United States Patent Application Publication US 2009/0326051 A1 - sequence listing, part 2

SEQ ID NO: 39984 - RNA, 22 nt, Homo sapiens
agcugaguguaggauguuuaca

SEQ ID NO: 39985 - RNA, 21 nt, Homo sapiens
ucaaucacagauagcaccccu

SEQ ID NO: 39986 - RNA, 23 nt, Homo sapiens
gggcucuuacucccucaggcacu

SEQ ID NO: 39987 - RNA, 19 nt, Homo sapiens
guccugaauuccgcagccu

SEQ ID NO: 39988 - RNA, 21 nt, Homo sapiens
gcuccaaccucagcagacugu

SEQ ID NO: 39989 - RNA, 22 nt, Homo sapiens
cacucuaaagggaggcacuuug

SEQ ID NO: 39990 - RNA, 24 nt, Homo sapiens
cacccccagagccucagcucccca

SEQ ID NO: 39991 - RNA, 21 nt, Homo sapiens
guguauaugcccauggacugc

SEQ ID NO: 39992 - RNA, 23 nt, Homo sapiens
aggaacagcagcagcccgggccg

SEQ ID NO: 39993 - RNA, 20 nt, Homo sapiens
uacugcuuccacagcucccc

SEQ ID NO: 39994 - RNA, 23 nt, Homo sapiens
ggacauuguuucagugcccaagu

SEQ ID NO: 39995 - RNA, 24 nt, Homo sapiens
acugggcacaaacauguccagguc

SEQ ID NO: 39996 - RNA, 20 nt, Homo sapiens
auuucuauaucuaucuccau

SEQ ID NO: 39997 - RNA, 17 nt, Homo sapiens
gggagaggaggaggcga

SEQ ID NO: 39998 - RNA, 22 nt, Homo sapiens
cuagggaacacagggcugguga

SEQ ID NO: 39999 - RNA, 22 nt, Homo sapiens
gagcccuggacuaggagucagc

SEQ ID NO: 40000 - RNA, 23 nt, Homo sapiens
ucauacagcuagauaaccaaaga
